United States Patent Application Publication US 2024/0131093 A1 - sequence listing, part 2

SEQ ID NO: 2005 - protein, 7 aa, synthetic construct
  source 1..7: note = Description of Artificial Sequence: Synthetic polypeptide
RPLPPLP

SEQ ID NO: 2006 - protein, 7 aa, synthetic construct
  source 1..7: note = Description of Artificial Sequence: Synthetic polypeptide
APPLPPR

SEQ ID NO: 2007 - protein, 12 aa, synthetic construct
  source 1..12: note = Description of Artificial Sequence: Synthetic polypeptide
DVFYPYPYASGS

SEQ ID NO: 2008 - protein, 6 aa, synthetic construct
  source 1..6: note = Description of Artificial Sequence: Synthetic polypeptide
MYWYPY

SEQ ID NO: 2009 - protein, 12 aa, synthetic construct
  source 1..12: note = Description of Artificial Sequence: Synthetic polypeptide
DITWDQLWDLMK

SEQ ID NO: 2010 - protein, 8 aa, synthetic construct
  source 1..8: note = Description of Artificial Sequence: Synthetic polypeptide
  VARIANT 5: note = misc_feature - Xaa is Gly or Leu
CWDDXWLC

SEQ ID NO: 2011 - protein, 14 aa, synthetic construct
  source 1..14: note = Description of Artificial Sequence: Synthetic polypeptide
EWCEYLGGYLRCYA

SEQ ID NO: 2012 - protein, 14 aa, synthetic construct
  source 1..14: note = Description of Artificial Sequence: Synthetic polypeptide
  VARIANT 2: note = misc_feature - Xaa can be any naturally occurring amino acid
  VARIANT 4..5: note = misc_feature - Xaa can be any naturally occurring amino acid
  VARIANT 8: note = misc_feature - Xaa can be any naturally occurring amino acid
  VARIANT 11: note = misc_feature - Xaa can be any naturally occurring amino acid
  VARIANT 13: note = misc_feature - Xaa can be any naturally occurring amino acid
YXCXXGPXTWXCXP

SEQ ID NO: 2013 - protein, 14 aa, synthetic construct
  source 1..14: note = Description of Artificial Sequence: Synthetic polypeptide
IEGPTLRQWLAARA

SEQ ID NO: 2014 - skipped

SEQ ID NO: 2015 - protein, 7 aa, synthetic construct
  source 1..7: note = Description of Artificial Sequence: Synthetic polypeptide
  VARIANT 1: note = misc_feature - Xaa can be any naturally occurring amino acid
  VARIANT 3..4: note = misc_feature - Xaa can be any naturally occurring amino acid
XFXXYLW

SEQ ID NO: 2016 - protein, 13 aa, synthetic construct
  source 1..13: note = Description of Artificial Sequence: Synthetic polypeptide
SSIISHFRWGLCD

SEQ ID NO: 2017 - protein, 13 aa, synthetic construct
  source 1..13: note = Description of Artificial Sequence: Synthetic polypeptide
MSRPACPPNDKYE

SEQ ID NO: 2018 - protein, 8 aa, synthetic construct
  source 1..8: note = Description of Artificial Sequence: Synthetic polypeptide
CLRSGRGC

SEQ ID NO: 2019 - protein, 9 aa, synthetic construct
  source 1..9: note = Description of Artificial Sequence: Synthetic polypeptide
CHWMFSPWC

SEQ ID NO: 2020 - skipped

SEQ ID NO: 2021 - protein, 8 aa, synthetic construct
  source 1..8: note = Description of Artificial Sequence: Synthetic polypeptide
CSSRLDAC

SEQ ID NO: 2022 - protein, 7 aa, synthetic construct
  source 1..7: note = Description of Artificial Sequence: Synthetic polypeptide
CLPVASC

SEQ ID NO: 2023 - protein, 13 aa, synthetic construct
  source 1..13: note = Description of Artificial Sequence: Synthetic polypeptide
CGFECVRQCPERC

SEQ ID NO: 2024 - protein, 13 aa, synthetic construct
  source 1..13: note = Description of Artificial Sequence: Synthetic polypeptide
CVALCREACGEGC

SEQ ID NO: 2025 - protein, 9 aa, synthetic construct
  source 1..9: note = Description of Artificial Sequence: Synthetic polypeptide
SWCEPGWCR

SEQ ID NO: 2026 - protein, 7 aa, synthetic construct
  source 1..7: note = Description of Artificial Sequence: Synthetic polypeptide
YSGKWGW

SEQ ID NO: 2027 - protein, 7 aa, synthetic construct
  source 1..7: note = Description of Artificial Sequence: Synthetic polypeptide
GLSGGRS

SEQ ID NO: 2028 - protein, 7 aa, synthetic construct
  source 1..7: note = Description of Artificial Sequence: Synthetic polypeptide
LMLPRAD

SEQ ID NO: 2029 - protein, 9 aa, synthetic construct
  source 1..9: note = Description of Artificial Sequence: Synthetic polypeptide
CSCFRDVCC

SEQ ID NO: 2030 - protein, 9 aa, synthetic construct
  source 1..9: note = Description of Artificial Sequence: Synthetic polypeptide
CRDVVSVIC

SEQ ID NO: 2031 - protein, 6 aa, synthetic construct
  source 1..6: note = Description of Artificial Sequence: Synthetic polypeptide
MARSGL

SEQ ID NO: 2032 - protein, 6 aa, synthetic construct
  source 1..6: note = Description of Artificial Sequence: Synthetic polypeptide
MARAKE

SEQ ID NO: 2033 - protein, 6 aa, synthetic construct
  source 1..6: note = Description of Artificial Sequence: Synthetic polypeptide
MSRTMS

SEQ ID NO: 2034 - protein, 6 aa, synthetic construct
  source 1..6: note = Description of Artificial Sequence: Synthetic polypeptide
KCCYSL

SEQ ID NO: 2035 - protein, 14 aa, synthetic construct
  source 1..14: note = Description of Artificial Sequence: Synthetic polypeptide
MYWGDSHWLQYWYE

SEQ ID NO: 2036 - protein, 7 aa, synthetic construct
  source 1..7: note = Description of Artificial Sequence: Synthetic polypeptide
MQLPLAT

SEQ ID NO: 2037 - protein, 4 aa, synthetic construct
  source 1..4: note = Description of Artificial Sequence: Synthetic polypeptide
EWLS

SEQ ID NO: 2038 - protein, 4 aa, synthetic construct
  source 1..4: note = Description of Artificial Sequence: Synthetic polypeptide
SNEW

SEQ ID NO: 2039 - protein, 4 aa, synthetic construct
  source 1..4: note = Description of Artificial Sequence: Synthetic polypeptide
TNYL

SEQ ID NO: 2040 - protein, 12 aa, synthetic construct
  source 1..12: note = Description of Artificial Sequence: Synthetic polypeptide
WDLAWMFRLPVG

SEQ ID NO: 2041 - protein, 13 aa, synthetic construct
  source 1..13: note = Description of Artificial Sequence: Synthetic polypeptide
CTVALPGGYVRVC

SEQ ID NO: 2042 - protein, 13 aa, synthetic construct
  source 1..13: note = Description of Artificial Sequence: Synthetic polypeptide
CVAYCIEHHCWTC

SEQ ID NO: 2043 - protein, 12 aa, synthetic construct
  source 1..12: note = Description of Artificial Sequence: Synthetic polypeptide
CVFAHNYDYLVC

SEQ ID NO: 2044 - protein, 10 aa, synthetic construct
  source 1..10: note = Description of Artificial Sequence: Synthetic polypeptide
CVFTSNYAFC

SEQ ID NO: 2045 - protein, 7 aa, synthetic construct
  source 1..7: note = Description of Artificial Sequence: Synthetic polypeptide
VHSPNKK

SEQ ID NO: 2046 - protein, 7 aa, synthetic construct
  source 1..7: note = Description of Artificial Sequence: Synthetic polypeptide
CRGDGWC

SEQ ID NO: 2047 - protein, 6 aa, synthetic construct
  source 1..6: note = Description of Artificial Sequence: Synthetic polypeptide
  VARIANT 1: note = misc_feature - Xaa can be any naturally occurring amino acid
  VARIANT 6: note = misc_feature - Xaa can be any naturally occurring amino acid
XRGCDX

SEQ ID NO: 2048 - skipped

SEQ ID NO: 2049 - protein, 11 aa, synthetic construct
  source 1..11: note = Description of Artificial Sequence: Synthetic polypeptide
SGKGPRQITAL

SEQ ID NO: 2050 - protein, 14 aa, synthetic construct
  source 1..14: note = Description of Artificial Sequence: Synthetic polypeptide
  VARIANT 10: note = misc_feature - Xaa is Ala or Gln
  VARIANT 11: note = misc_feature - Xaa is Asn or Ala
  VARIANT 12..14: note = misc_feature - Xaa can be any naturally occurring amino acid
AAAAAAAAAXXXXX

SEQ ID NO: 2051 - protein, 6 aa, synthetic construct
  source 1..6: note = Description of Artificial Sequence: Synthetic polypeptide
VYMSPF

SEQ ID NO: 2052 - protein, 7 aa, synthetic construct
  source 1..7: note = Description of Artificial Sequence: Synthetic polypeptide
ATWLPPR

SEQ ID NO: 2053 - protein, 12 aa, synthetic construct
  source 1..12: note = Description of Artificial Sequence: Synthetic polypeptide
HTMYYHHYQHHL

SEQ ID NO: 2054 - protein, 19 aa, synthetic construct
  source 1..19: note = Description of Artificial Sequence: Synthetic polypeptide
SEVGCRAGPLQWLCEKYFG

SEQ ID NO: 2055 - protein, 18 aa, synthetic construct
  source 1..18: note = Description of Artificial Sequence: Synthetic polypeptide
CGLLPVGRPDRNVWRWLC

SEQ ID NO: 2056 - protein, 15 aa, synthetic construct
  source 1..15: note = Description of Artificial Sequence: Synthetic polypeptide
CKGQCDRFKGLPWEC

SEQ ID NO: 2057 - protein, 5 aa, synthetic construct
  source 1..5: note = Description of Artificial Sequence: Synthetic polypeptide
SGRSA

SEQ ID NO: 2058 - protein, 4 aa, synthetic construct
  source 1..4: note = Description of Artificial Sequence: Synthetic polypeptide
WGFP

SEQ ID NO: 2059 - protein, 17 aa, synthetic construct
  source 1..17: note = Description of Artificial Sequence: Synthetic polypeptide
AEPMPHSLNFSQYLWYT

SEQ ID NO: 2060 - protein, 6 aa, synthetic construct
  source 1..6: note = Description of Artificial Sequence: Synthetic polypeptide
  VARIANT 4: note = misc_feature - Xaa is Trp or Phe
WAYXSP

SEQ ID NO: 2061 - protein, 7 aa, synthetic construct
  source 1..7: note = Description of Artificial Sequence: Synthetic polypeptide
IELLQAR

SEQ ID NO: 2062 - protein, 16 aa, synthetic construct
  source 1..16: note = Description of Artificial Sequence: Synthetic polypeptide
AYTKCSRQWRTCMTTH

SEQ ID NO: 2063 - protein, 15 aa, synthetic construct
  source 1..15: note = Description of Artificial Sequence: Synthetic polypeptide
PQNSKIPGPTFLDPH

SEQ ID NO: 2064 - protein, 15 aa, synthetic construct
  source 1..15: note = Description of Artificial Sequence: Synthetic polypeptide
SMEPALPDWWWKMFK

SEQ ID NO: 2065 - protein, 16 aa, synthetic construct
  source 1..16: note = Description of Artificial Sequence: Synthetic polypeptide
ANTPCGPYTHDCPVKR

SEQ ID NO: 2066 - protein, 12 aa, synthetic construct
  source 1..12: note = Description of Artificial Sequence: Synthetic polypeptide
TACHQHVRMVRP

SEQ ID NO: 2067 - protein, 12 aa, synthetic construct
  source 1..12: note = Description of Artificial Sequence: Synthetic polypeptide
VPWMEPAYQRFL

SEQ ID NO: 2068 - protein, 8 aa, synthetic construct
  source 1..8: note = Description of Artificial Sequence: Synthetic polypeptide
DPRATPGS

SEQ ID NO: 2069 - protein, 12 aa, synthetic construct
  source 1..12: note = Description of Artificial Sequence: Synthetic polypeptide
FRPNRAQDYNTN

SEQ ID NO: 2070 - protein, 9 aa, synthetic construct
  source 1..9: note = Description of Artificial Sequence: Synthetic polypeptide
CTKNSYLMC

SEQ ID NO: 2071 - protein, 11 aa, synthetic construct
  source 1..11: note = Description of Artificial Sequence: Synthetic polypeptide
  VARIANT 2: note = misc_feature - Xaa is Gln or Arg
  VARIANT 3: note = misc_feature - Xaa is Leu or Arg
  VARIANT 5: note = misc_feature - Xaa is Gly or Asn
  VARIANT 6..7: note = misc_feature - Xaa is any amino acid residue
  VARIANT 9: note = misc_feature - Xaa iis Ala or Val
CXXTXXXGXGC

SEQ ID NO: 2072 - protein, 9 aa, synthetic construct
  source 1..9: note = Description of Artificial Sequence: Synthetic polypeptide
CPIEDRPMC

SEQ ID NO: 2073 - protein, 12 aa, synthetic construct
  source 1..12: note = Description of Artificial Sequence: Synthetic polypeptide
HEWSYLAPYPWF

SEQ ID NO: 2074 - protein, 9 aa, synthetic construct
  source 1..9: note = Description of Artificial Sequence: Synthetic polypeptide
MCPKHPLGC

SEQ ID NO: 2075 - protein, 15 aa, synthetic construct
  source 1..15: note = Description of Artificial Sequence: Synthetic polypeptide
RMWPSSTVNLSAGRR

SEQ ID NO: 2076 - protein, 20 aa, synthetic construct
  source 1..20: note = Description of Artificial Sequence: Synthetic polypeptide
SAKTAVSQRVWLPSHRGGEP

SEQ ID NO: 2077 - protein, 20 aa, synthetic construct
  source 1..20: note = Description of Artificial Sequence: Synthetic polypeptide
KSREHVNNSACPSKRITAAL

SEQ ID NO: 2078 - protein, 4 aa, synthetic construct
  source 1..4: note = Description of Artificial Sequence: Synthetic polypeptide
EGFR

SEQ ID NO: 2079 - protein, 6 aa, synthetic construct
  source 1..6: note = Description of Artificial Sequence: Synthetic polypeptide
AGLGVR

SEQ ID NO: 2080 - protein, 15 aa, synthetic construct
  source 1..15: note = Description of Artificial Sequence: Synthetic polypeptide
GTRQGHTMRLGVSDG

SEQ ID NO: 2081 - protein, 15 aa, synthetic construct
  source 1..15: note = Description of Artificial Sequence: Synthetic polypeptide
IAGLATPGWSHWLAL

SEQ ID NO: 2082 - protein, 7 aa, synthetic construct
  source 1..7: note = Description of Artificial Sequence: Synthetic polypeptide
SMSIARL

SEQ ID NO: 2083 - protein, 7 aa, synthetic construct
  source 1..7: note = Description of Artificial Sequence: Synthetic polypeptide
HTFEPGV

SEQ ID NO: 2084 - protein, 15 aa, synthetic construct
  source 1..15: note = Description of Artificial Sequence: Synthetic polypeptide
NTSLKRISNKRIRRK

SEQ ID NO: 2085 - protein, 15 aa, synthetic construct
  source 1..15: note = Description of Artificial Sequence: Synthetic polypeptide
LRIKRKRRKRKKTRK

SEQ ID NO: 2086 - DNA, 21 bp, Adeno-associated virus 2
  source 1..21: mol_type = unassigned DNA
  misc_difference 3: note = misc_feature - n is a, c, g, or t
agnvvmdcaggarscascaac

SEQ ID NO: 2087 - protein, 7 aa, synthetic construct
  source 1..7: note = Description of Artificial Sequence: Synthetic polypeptide
SDSGASN

SEQ ID NO: 2088 - protein, 7 aa, synthetic construct
  source 1..7: note = Description of Artificial Sequence: Synthetic polypeptide
SPSGASN

SEQ ID NO: 2089 - protein, 7 aa, synthetic construct
  source 1..7: note = Description of Artificial Sequence: Synthetic polypeptide
SHSGASN

SEQ ID NO: 2090 - protein, 7 aa, synthetic construct
  source 1..7: note = Description of Artificial Sequence: Synthetic polypeptide
SRSGASN

SEQ ID NO: 2091 - protein, 7 aa, synthetic construct
  source 1..7: note = Description of Artificial Sequence: Synthetic polypeptide
SKSGASN

SEQ ID NO: 2092 - protein, 7 aa, synthetic construct
  source 1..7: note = Description of Artificial Sequence: Synthetic polypeptide
SNSGASN

SEQ ID NO: 2093 - protein, 7 aa, synthetic construct
  source 1..7: note = Description of Artificial Sequence: Synthetic polypeptide
SGSGASN

SEQ ID NO: 2094 - protein, 7 aa, synthetic construct
  source 1..7: note = Description of Artificial Sequence: Synthetic polypeptide
SASGASN

SEQ ID NO: 2095 - protein, 7 aa, synthetic construct
  source 1..7: note = Description of Artificial Sequence: Synthetic polypeptide
SESGTSN

SEQ ID NO: 2096 - protein, 7 aa, synthetic construct
  source 1..7: note = Description of Artificial Sequence: Synthetic polypeptide
STTGGSN

SEQ ID NO: 2097 - protein, 7 aa, synthetic construct
  source 1..7: note = Description of Artificial Sequence: Synthetic polypeptide
SSAGSTN

SEQ ID NO: 2098 - protein, 6 aa, synthetic construct
  source 1..6: note = Description of Artificial Sequence: Synthetic polypeptide
NNDSQA

SEQ ID NO: 2099 - protein, 6 aa, synthetic construct
  source 1..6: note = Description of Artificial Sequence: Synthetic polypeptide
NNRNQA

SEQ ID NO: 2100 - protein, 6 aa, synthetic construct
  source 1..6: note = Description of Artificial Sequence: Synthetic polypeptide
NNNKQA

SEQ ID NO: 2101 - protein, 6 aa, synthetic construct
  source 1..6: note = Description of Artificial Sequence: Synthetic polypeptide
NAKRQA

SEQ ID NO: 2102 - protein, 6 aa, synthetic construct
  source 1..6: note = Description of Artificial Sequence: Synthetic polypeptide
NDEHQA

SEQ ID NO: 2103 - protein, 6 aa, synthetic construct
  source 1..6: note = Description of Artificial Sequence: Synthetic polypeptide
NTSQKA

SEQ ID NO: 2104 - protein, 25 aa, synthetic construct
  source 1..25: note = Description of Artificial Sequence: Synthetic polypeptide
YYLSRTNTPSGTDTQSRLVFSQAGA

SEQ ID NO: 2105 - protein, 25 aa, synthetic construct
  source 1..25: note = Description of Artificial Sequence: Synthetic polypeptide
YYLSRTNTDSGTETQSGLDFSQAGA

SEQ ID NO: 2106 - protein, 25 aa, synthetic construct
  source 1..25: note = Description of Artificial Sequence: Synthetic polypeptide
YYLSRTNTESGTPTQSALEFSQAGA

SEQ ID NO: 2107 - protein, 25 aa, synthetic construct
  source 1..25: note = Description of Artificial Sequence: Synthetic polypeptide
YYLSRTNTHSGTHTQSPLHFSQAGA

SEQ ID NO: 2108 - protein, 25 aa, synthetic construct
  source 1..25: note = Description of Artificial Sequence: Synthetic polypeptide
YYLSRTNTSSGTITISHLIFSQAGA

SEQ ID NO: 2109 - protein, 25 aa, synthetic construct
  source 1..25: note = Description of Artificial Sequence: Synthetic polypeptide
YYLSRTNTRSGIMTKSSLMFSQAGA

SEQ ID NO: 2110 - protein, 25 aa, synthetic construct
  source 1..25: note = Description of Artificial Sequence: Synthetic polypeptide
YYLSRTNTKSGRKTLSNLSFSQAGA

SEQ ID NO: 2111 - protein, 25 aa, synthetic construct
  source 1..25: note = Description of Artificial Sequence: Synthetic polypeptide
YYLSRTNDGSGPVTPSKLRFSQRGA

SEQ ID NO: 2112 - protein, 25 aa, synthetic construct
  source 1..25: note = Description of Artificial Sequence: Synthetic polypeptide
YYLSRTNAASGHATHSDLKFSQPGA

SEQ ID NO: 2113 - protein, 25 aa, synthetic construct
  source 1..25: note = Description of Artificial Sequence: Synthetic polypeptide
YYLSRTNGQAGSLTMSELGFSQVGA

SEQ ID NO: 2114 - protein, 25 aa, synthetic construct
  source 1..25: note = Description of Artificial Sequence: Synthetic polypeptide
YYLSRTNSTGGNQTTSQLLFSQLSA

SEQ ID NO: 2115 - protein, 25 aa, synthetic construct
  source 1..25: note = Description of Artificial Sequence: Synthetic polypeptide
YFLSRTNNNTGLNTNSTLNFSQGRA

SEQ ID NO: 2116 - protein, 16 aa, synthetic construct
  source 1..16: note = Description of Artificial Sequence: Synthetic polypeptide
SKTGADNNNSEYSWTG

SEQ ID NO: 2117 - protein, 16 aa, synthetic construct
  source 1..16: note = Description of Artificial Sequence: Synthetic polypeptide
SKTDADNNNSEYSWTG

SEQ ID NO: 2118 - protein, 16 aa, synthetic construct
  source 1..16: note = Description of Artificial Sequence: Synthetic polypeptide
SKTEADNNNSEYSWTG

SEQ ID NO: 2119 - protein, 16 aa, synthetic construct
  source 1..16: note = Description of Artificial Sequence: Synthetic polypeptide
SKTPADNNNSEYSWTG

SEQ ID NO: 2120 - protein, 16 aa, synthetic construct
  source 1..16: note = Description of Artificial Sequence: Synthetic polypeptide
SKTHADNNNSEYSWTG

SEQ ID NO: 2121 - protein, 16 aa, synthetic construct
  source 1..16: note = Description of Artificial Sequence: Synthetic polypeptide
SKTQADNNNSEYSWTG

SEQ ID NO: 2122 - protein, 16 aa, synthetic construct
  source 1..16: note = Description of Artificial Sequence: Synthetic polypeptide
SKTIADNNNSEYSWTG

SEQ ID NO: 2123 - protein, 16 aa, synthetic construct
  source 1..16: note = Description of Artificial Sequence: Synthetic polypeptide
SKTMADNNNSEYSWTG

SEQ ID NO: 2124 - protein, 16 aa, synthetic construct
  source 1..16: note = Description of Artificial Sequence: Synthetic polypeptide
SKTRADNNNSEYSWTG

SEQ ID NO: 2125 - protein, 16 aa, synthetic construct
  source 1..16: note = Description of Artificial Sequence: Synthetic polypeptide
SKTNADNNNSEYSWTG

SEQ ID NO: 2126 - protein, 16 aa, synthetic construct
  source 1..16: note = Description of Artificial Sequence: Synthetic polypeptide
SKTVGRNNNSEYSWTG

SEQ ID NO: 2127 - protein, 16 aa, synthetic construct
  source 1..16: note = Description of Artificial Sequence: Synthetic polypeptide
SKTADRNNNSEYSWTG

SEQ ID NO: 2128 - protein, 16 aa, synthetic construct
  source 1..16: note = Description of Artificial Sequence: Synthetic polypeptide
SKKLSQNNNSKYSWQG

SEQ ID NO: 2129 - protein, 16 aa, synthetic construct
  source 1..16: note = Description of Artificial Sequence: Synthetic polypeptide
SKPTTGNNNSDYSWPG

SEQ ID NO: 2130 - protein, 16 aa, synthetic construct
  source 1..16: note = Description of Artificial Sequence: Synthetic polypeptide
STQKNENNNSNYSWPG

SEQ ID NO: 2131 - protein, 8 aa, synthetic construct
  source 1..8: note = Description of Artificial Sequence: Synthetic polypeptide
HKDDEGKF

SEQ ID NO: 2132 - protein, 8 aa, synthetic construct
  source 1..8: note = Description of Artificial Sequence: Synthetic polypeptide
HKDDNRKF

SEQ ID NO: 2133 - protein, 8 aa, synthetic construct
  source 1..8: note = Description of Artificial Sequence: Synthetic polypeptide
HKDDTNKF

SEQ ID NO: 2134 - protein, 8 aa, synthetic construct
  source 1..8: note = Description of Artificial Sequence: Synthetic polypeptide
HEDSDKNF

SEQ ID NO: 2135 - protein, 8 aa, synthetic construct
  source 1..8: note = Description of Artificial Sequence: Synthetic polypeptide
HRDGADSF

SEQ ID NO: 2136 - protein, 8 aa, synthetic construct
  source 1..8: note = Description of Artificial Sequence: Synthetic polypeptide
HGDNKSRF

SEQ ID NO: 2137 - protein, 14 aa, synthetic construct
  source 1..14: note = Description of Artificial Sequence: Synthetic polypeptide
KQGSEKTNVDFEEV

SEQ ID NO: 2138 - protein, 14 aa, synthetic construct
  source 1..14: note = Description of Artificial Sequence: Synthetic polypeptide
KQGSEKTNVDSEEV

SEQ ID NO: 2139 - protein, 14 aa, synthetic construct
  source 1..14: note = Description of Artificial Sequence: Synthetic polypeptide
KQGSEKTNVDVEEV

SEQ ID NO: 2140 - protein, 14 aa, synthetic construct
  source 1..14: note = Description of Artificial Sequence: Synthetic polypeptide
KQGSDKTNVDDAGV

SEQ ID NO: 2141 - protein, 14 aa, synthetic construct
  source 1..14: note = Description of Artificial Sequence: Synthetic polypeptide
KQGSSKTNVDPREV

SEQ ID NO: 2142 - protein, 14 aa, synthetic construct
  source 1..14: note = Description of Artificial Sequence: Synthetic polypeptide
KQGSRKTNVDHKQV

SEQ ID NO: 2143 - protein, 14 aa, synthetic construct
  source 1..14: note = Description of Artificial Sequence: Synthetic polypeptide
KQGSKGGNVDTNRV

SEQ ID NO: 2144 - protein, 14 aa, synthetic construct
  source 1..14: note = Description of Artificial Sequence: Synthetic polypeptide
KQGSGEANVDNGDV

SEQ ID NO: 2145 - protein, 14 aa, synthetic construct
  source 1..14: note = Description of Artificial Sequence: Synthetic polypeptide
KQDAAADNIDYDHV

SEQ ID NO: 2146 - protein, 14 aa, synthetic construct
  source 1..14: note = Description of Artificial Sequence: Synthetic polypeptide
KQSGTRSNAAASSV

SEQ ID NO: 2147 - protein, 14 aa, synthetic construct
  source 1..14: note = Description of Artificial Sequence: Synthetic polypeptide
KENTNTNDTELTNV

SEQ ID NO: 2148 - protein, 14 aa, synthetic construct
  source 1..14: note = Description of Artificial Sequence: Synthetic polypeptide
QRGNNVAATADVNT

SEQ ID NO: 2149 - protein, 14 aa, synthetic construct
  source 1..14: note = Description of Artificial Sequence: Synthetic polypeptide
QRGNNEAATADVNT

SEQ ID NO: 2150 - protein, 14 aa, synthetic construct
  source 1..14: note = Description of Artificial Sequence: Synthetic polypeptide
QRGNNPAATADVNT

SEQ ID NO: 2151 - protein, 14 aa, synthetic construct
  source 1..14: note = Description of Artificial Sequence: Synthetic polypeptide
QRGNNHAATADVNT

SEQ ID NO: 2152 - protein, 14 aa, synthetic construct
  source 1..14: note = Description of Artificial Sequence: Synthetic polypeptide
QEENNIAATPGVNT

SEQ ID NO: 2153 - protein, 14 aa, synthetic construct
  source 1..14: note = Description of Artificial Sequence: Synthetic polypeptide
QPPNNMAATHEVNT

SEQ ID NO: 2154 - protein, 14 aa, synthetic construct
  source 1..14: note = Description of Artificial Sequence: Synthetic polypeptide
QHHNNSAATTIVNT

SEQ ID NO: 2155 - protein, 14 aa, synthetic construct
  source 1..14: note = Description of Artificial Sequence: Synthetic polypeptide
QTTNNRAAFNMVET

SEQ ID NO: 2156 - protein, 14 aa, synthetic construct
  source 1..14: note = Description of Artificial Sequence: Synthetic polypeptide
QKKNNNAASKKVAT

SEQ ID NO: 2157 - protein, 14 aa, synthetic construct
  source 1..14: note = Description of Artificial Sequence: Synthetic polypeptide
QGGNNKAADDAVKT

SEQ ID NO: 2158 - protein, 14 aa, synthetic construct
  source 1..14: note = Description of Artificial Sequence: Synthetic polypeptide
QAAKGGAADDAVKT

SEQ ID NO: 2159 - protein, 14 aa, synthetic construct
  source 1..14: note = Description of Artificial Sequence: Synthetic polypeptide
QDDRAAAANESVDT

SEQ ID NO: 2160 - protein, 14 aa, synthetic construct
  source 1..14: note = Description of Artificial Sequence: Synthetic polypeptide
QQQHDDAAYQRVHT

SEQ ID NO: 2161 - protein, 14 aa, synthetic construct
  source 1..14: note = Description of Artificial Sequence: Synthetic polypeptide
QSSSSLAAVSTVQT

SEQ ID NO: 2162 - protein, 14 aa, synthetic construct
  source 1..14: note = Description of Artificial Sequence: Synthetic polypeptide
QNNQTTAAIRNVTT

SEQ ID NO: 2163 - protein, 12 aa, synthetic construct
  source 1..12: note = Description of Artificial Sequence: Synthetic polypeptide
NYNKKSDNVDFT

SEQ ID NO: 2164 - protein, 12 aa, synthetic construct
  source 1..12: note = Description of Artificial Sequence: Synthetic polypeptide
NYNKKSENVDFT

SEQ ID NO: 2165 - protein, 12 aa, synthetic construct
  source 1..12: note = Description of Artificial Sequence: Synthetic polypeptide
NYNKKSLNVDFT

SEQ ID NO: 2166 - protein, 12 aa, synthetic construct
  source 1..12: note = Description of Artificial Sequence: Synthetic polypeptide
NYNKKSPNVDFT

SEQ ID NO: 2167 - protein, 12 aa, synthetic construct
  source 1..12: note = Description of Artificial Sequence: Synthetic polypeptide
NYSKKSHCVDFT

SEQ ID NO: 2168 - protein, 11 aa, synthetic construct
  source 1..11: note = Description of Artificial Sequence: Synthetic polypeptide
NYRKTIYVDFT

SEQ ID NO: 2169 - protein, 11 aa, synthetic construct
  source 1..11: note = Description of Artificial Sequence: Synthetic polypeptide
NYKEKKDVHFT

SEQ ID NO: 2170 - protein, 11 aa, synthetic construct
  source 1..11: note = Description of Artificial Sequence: Synthetic polypeptide
NYGHRAIVQFT

SEQ ID NO: 2171 - protein, 11 aa, synthetic construct
  source 1..11: note = Description of Artificial Sequence: Synthetic polypeptide
NYANHQFVVCT

SEQ ID NO: 2172 - protein, 12 aa, synthetic construct
  source 1..12: note = Description of Artificial Sequence: Synthetic polypeptide
NYDDDPTGVLLT

SEQ ID NO: 2173 - protein, 11 aa, synthetic construct
  source 1..11: note = Description of Artificial Sequence: Synthetic polypeptide
NYDDPTGVLLT

SEQ ID NO: 2174 - protein, 11 aa, synthetic construct
  source 1..11: note = Description of Artificial Sequence: Synthetic polypeptide
NFEQQNSVEWT

SEQ ID NO: 2175 - protein, 7 aa, synthetic construct
  source 1..7: note = Description of Artificial Sequence: Synthetic polypeptide
SQSGASN

SEQ ID NO: 2176 - protein, 6 aa, synthetic construct
  source 1..6: note = Description of Artificial Sequence: Synthetic polypeptide
NNGSQA

SEQ ID NO: 2177 - protein, 25 aa, synthetic construct
  source 1..25: note = Description of Artificial Sequence: Synthetic polypeptide
YYLSRTNTPSGTTTWSRLQFSQAGA

SEQ ID NO: 2178 - protein, 16 aa, synthetic construct
  source 1..16: note = Description of Artificial Sequence: Synthetic polypeptide
SKTSADNNNSEYSWTG

SEQ ID NO: 2179 - protein, 8 aa, synthetic construct
  source 1..8: note = Description of Artificial Sequence: Synthetic polypeptide
HKDDEEKF

SEQ ID NO: 2180 - protein, 14 aa, synthetic construct
  source 1..14: note = Description of Artificial Sequence: Synthetic polypeptide
KQGSEKTNVDIEEV

SEQ ID NO: 2181 - protein, 14 aa, synthetic construct
  source 1..14: note = Description of Artificial Sequence: Synthetic polypeptide
QRGNNQAATADVNT

SEQ ID NO: 2182 - protein, 12 aa, synthetic construct
  source 1..12: note = Description of Artificial Sequence: Synthetic polypeptide
NYNKKSVNVDFT

SEQ ID NO: 2183 - protein, 42 aa, synthetic construct
  source 1..42: note = Description of Artificial Sequence: Synthetic polypeptide
SQSGASNYNTPSGTTTQSRLQFSTSADNNNSEYSWTGATKYH

SEQ ID NO: 2184 - protein, 42 aa, synthetic construct
  source 1..42: note = Description of Artificial Sequence: Synthetic polypeptide
SASGASNFNSEGGSLTQSSLGFSTDGENNNSDFSWTGATKYH

SEQ ID NO: 2185 - protein, 42 aa, synthetic construct
  source 1..42: note = Description of Artificial Sequence: Synthetic polypeptide
SQSGASNYNTPSGTTTQSRLQFSTDGENNNSDFSWTGATKYH

SEQ ID NO: 2186 - protein, 42 aa, synthetic construct
  source 1..42: note = Description of Artificial Sequence: Synthetic polypeptide
SASGASNYNTPSGTTTQSRLQFSTSADNNNSEFSWPGATTYH

SEQ ID NO: 2187 - protein, 42 aa, synthetic construct
  source 1..42: note = Description of Artificial Sequence: Synthetic polypeptide
SQSGASNFNSEGGSLTQSSLGFSTDGENNNSDFSWTGATKYH

SEQ ID NO: 2188 - protein, 42 aa, synthetic construct
  source 1..42: note = Description of Artificial Sequence: Synthetic polypeptide
SASGASNYNTPSGSLTQSSLGFSTDGENNNSDFSWTGATKYH

SEQ ID NO: 2189 - protein, 42 aa, synthetic construct
  source 1..42: note = Description of Artificial Sequence: Synthetic polypeptide
SQSGASNYNTPSGTTTQSRLQFSTSADNNNSDFSWTGATKYH

SEQ ID NO: 2190 - protein, 42 aa, synthetic construct
  source 1..42: note = Description of Artificial Sequence: Synthetic polypeptide
SGAGASNFNSEGGSLTQSSLGFSTDGENNNSDFSWTGATKYH

SEQ ID NO: 2191 - protein, 7 aa, synthetic construct
  source 1..7: note = Description of Artificial Sequence: Synthetic polypeptide
SGAGASN

SEQ ID NO: 2192 - protein, 15 aa, synthetic construct
  source 1..15: note = Description of Artificial Sequence: Synthetic polypeptide
NSEGGSLTQSSLGFS

SEQ ID NO: 2193 - protein, 11 aa, synthetic construct
  source 1..11: note = Description of Artificial Sequence: Synthetic polypeptide
TDGENNNSDFS

SEQ ID NO: 2194 - protein, 10 aa, synthetic construct
  source 1..10: note = Description of Artificial Sequence: Synthetic polypeptide
SEFSWPGATT

SEQ ID NO: 2195 - protein, 13 aa, synthetic construct
  source 1..13: note = Description of Artificial Sequence: Synthetic polypeptide
TSADNNNSDFSWT

SEQ ID NO: 2196 - protein, 8 aa, synthetic construct
  source 1..8: note = Description of Artificial Sequence: Synthetic polypeptide
SQSGASNY

SEQ ID NO: 2197 - protein, 15 aa, synthetic construct
  source 1..15: note = Description of Artificial Sequence: Synthetic polypeptide
NTPSGTTTQSRLQFS

SEQ ID NO: 2198 - protein, 19 aa, synthetic construct
  source 1..19: note = Description of Artificial Sequence: Synthetic polypeptide
TSADNNNSEYSWTGATKYH

SEQ ID NO: 2199 - protein, 8 aa, synthetic construct
  source 1..8: note = Description of Artificial Sequence: Synthetic polypeptide
SASGASNF

SEQ ID NO: 2200 - protein, 19 aa, synthetic construct
  source 1..19: note = Description of Artificial Sequence: Synthetic polypeptide
TDGENNNSDFSWTGATKYH

SEQ ID NO: 2201 - protein, 8 aa, synthetic construct
  source 1..8: note = Description of Artificial Sequence: Synthetic polypeptide
SASGASNY

SEQ ID NO: 2202 - protein, 19 aa, synthetic construct
  source 1..19: note = Description of Artificial Sequence: Synthetic polypeptide
TSADNNNSEFSWPGATTYH

SEQ ID NO: 2203 - protein, 15 aa, synthetic construct
  source 1..15: note = Description of Artificial Sequence: Synthetic polypeptide
NTPSGSLTQSSLGFS

SEQ ID NO: 2204 - protein, 19 aa, synthetic construct
  source 1..19: note = Description of Artificial Sequence: Synthetic polypeptide
TSADNNNSDFSWTGATKYH

SEQ ID NO: 2205 - protein, 8 aa, synthetic construct
  source 1..8: note = Description of Artificial Sequence: Synthetic polypeptide
SGAGASNF

SEQ ID NO: 2206 - protein, 48 aa, synthetic construct
  source 1..48: note = Description of Artificial Sequence: Synthetic polypeptide
CTCCAGVVSVVSMRSRVCVNSGCAGCTDHCVVSRNSGTCVMSACACAA

SEQ ID NO: 2207 - protein, 48 aa, synthetic construct
  source 1..48: note = Description of Artificial Sequence: Synthetic polypeptide
CTCCAGAGAGGCAACAGACAAGCAGCTACCGCAGATGTCAACACACAA

SEQ ID NO: 2208 - protein, 7 aa, synthetic construct
  source 1..7: note = Description of Artificial Sequence: Synthetic polypeptide
SAAGASN

SEQ ID NO: 2209 - protein, 24 aa, synthetic construct
  source 1..24: note = Description of Artificial Sequence: Synthetic polypeptide
YFLSRTNTESGSTTQSTLRFSQAG

SEQ ID NO: 2210 - protein, 13 aa, synthetic construct
  source 1..13: note = Description of Artificial Sequence: Synthetic polypeptide
SKTSADNNNSDFS

SEQ ID NO: 2211 - protein, 14 aa, synthetic construct
  source 1..14: note = Description of Artificial Sequence: Synthetic polypeptide
KQGSEKTDVDIDKV

SEQ ID NO: 2212 - protein, 7 aa, synthetic construct
  source 1..7: note = Description of Artificial Sequence: Synthetic polypeptide
STAGASN

SEQ ID NO: 2213 - protein, 24 aa, synthetic construct
  source 1..24: note = Description of Artificial Sequence: Synthetic polypeptide
YFLSRTNTTSGIETQSTLRFSQAG

SEQ ID NO: 2214 - protein, 13 aa, synthetic construct
  source 1..13: note = Description of Artificial Sequence: Synthetic polypeptide
SKTDGENNNSDFS

SEQ ID NO: 2215 - protein, 14 aa, synthetic construct
  source 1..14: note = Description of Artificial Sequence: Synthetic polypeptide
KQGAAADDVEIDGV

SEQ ID NO: 2216 - protein, 7 aa, synthetic construct
  source 1..7: note = Description of Artificial Sequence: Synthetic polypeptide
SEAGASN

SEQ ID NO: 2217 - protein, 24 aa, synthetic construct
  source 1..24: note = Description of Artificial Sequence: Synthetic polypeptide
YYLSRTNTPSGTTTQSRLQFSQAG

SEQ ID NO: 2218 - protein, 13 aa, synthetic construct
  source 1..13: note = Description of Artificial Sequence: Synthetic polypeptide
SKTSADNNNSEYS

SEQ ID NO: 2219 - protein, 14 aa, synthetic construct
  source 1..14: note = Description of Artificial Sequence: Synthetic polypeptide
KQGSEKTNVDIEKV

SEQ ID NO: 2220 - protein, 24 aa, synthetic construct
  source 1..24: note = Description of Artificial Sequence: Synthetic polypeptide
YFLSRTNDASGSDTKSTLLFSQAG

SEQ ID NO: 2221 - protein, 13 aa, synthetic construct
  source 1..13: note = Description of Artificial Sequence: Synthetic polypeptide
STTPSENNNSEYS

SEQ ID NO: 2222 - protein, 7 aa, synthetic construct
  source 1..7: note = Description of Artificial Sequence: Synthetic polypeptide
SAAGATN

SEQ ID NO: 2223 - protein, 24 aa, synthetic construct
  source 1..24: note = Description of Artificial Sequence: Synthetic polypeptide
YFLSRTNGEAGSATLSELRFSQAG

SEQ ID NO: 2224 - protein, 8 aa, synthetic construct
  source 1..8: note = Description of Artificial Sequence: Synthetic polypeptide
HGDDADRF

SEQ ID NO: 2225 - protein, 14 aa, synthetic construct
  source 1..14: note = Description of Artificial Sequence: Synthetic polypeptide
KQGAEKSDVEVDRV

SEQ ID NO: 2226 - protein, 14 aa, synthetic construct
  source 1..14: note = Description of Artificial Sequence: Synthetic polypeptide
KQDSGGDNIDIDQV

SEQ ID NO: 2227 - protein, 7 aa, synthetic construct
  source 1..7: note = Description of Artificial Sequence: Synthetic polypeptide
SDAGASN

SEQ ID NO: 2228 - protein, 24 aa, synthetic construct
  source 1..24: note = Description of Artificial Sequence: Synthetic polypeptide
YFLSRTNTEGGHDTQSTLRFSQAG

SEQ ID NO: 2229 - protein, 14 aa, synthetic construct
  source 1..14: note = Description of Artificial Sequence: Synthetic polypeptide
KEDGGGSDVAIDEV

SEQ ID NO: 2230 - protein, 7 aa, synthetic construct
  source 1..7: note = Description of Artificial Sequence: Synthetic polypeptide
SNAGASN

SEQ ID NO: 2231 - protein, 24 aa, synthetic construct
  source 1..24: note = Description of Artificial Sequence: Synthetic polypeptide
YFLSRTNGEAGSATLSELRFSQPG

SEQ ID NO: 2232 - DNA, 21 bp, synthetic construct
  source 1..21: mol_type = other DNA; note = Description of Artificial Sequence: Synthetic polynucleotide
agcvvmdcaggarscascaac

SEQ ID NO: 2233 - DNA, 18 bp, synthetic construct
  source 1..18: mol_type = other DNA; note = Description of Artificial Sequence: Synthetic polynucleotide
aacracrrsmrsmaggca

SEQ ID NO: 2234 - DNA, 24 bp, synthetic construct
  source 1..24: mol_type = other DNA; note = Description of Artificial Sequence: Synthetic polynucleotide
cacrrggacrrcrmsrrsarsttt

SEQ ID NO: 2235 - DNA, 75 bp, synthetic construct
  source 1..75: mol_type = other DNA; note = Description of Artificial Sequence: Synthetic polynucleotide
  misc_difference 35: note = misc_feature - n is a, c, t, or g
tatttcttgagcagaacaaacrvcvvsrscggamncvhsacgmhstcavvscttvdsttttctcagsbcrgsgcg

SEQ ID NO: 2236 - DNA, 48 bp, synthetic construct
  source 1..48: mol_type = other DNA; note = Description of Artificial Sequence: Synthetic polynucleotide
tcaamammavnsrvcsrsaacaacaacagtrasttctcgtggmmagga

SEQ ID NO: 2237 - DNA, 42 bp, synthetic construct
  source 1..42: mol_type = other DNA; note = Description of Artificial Sequence: Synthetic polynucleotide
  misc_difference 31: note = misc_feature - n is a, c, t or g
aagsaarrcrscrvsrvarvcratrycgmsnhcrvmvrsgtc

SEQ ID NO: 2238 - DNA, 42 bp, synthetic construct
  source 1..42: mol_type = other DNA; note = Description of Artificial Sequence: Synthetic polynucleotide
  misc_difference 17: note = misc_feature - n is a, c, g, or t
  misc_difference 32: note = misc_feature - n is a, c, g, or t
cagvvsvvsmrsrvcvnsgcagctdhcvvsrnsgtcvmsaca

SEQ ID NO: 2239 - DNA, 33 bp, synthetic construct
  source 1..33: mol_type = other DNA; note = Description of Artificial Sequence: Synthetic polynucleotide
aactwcrvsvasmvsvhsddtgtgswstksact

SEQ ID NO: 2240 - DNA, 30 bp, synthetic construct
  source 1..30: mol_type = other DNA; note = Description of Artificial Sequence: Synthetic polynucleotide
ttgttgaacatcaccacgtgacgcacgttc

SEQ ID NO: 2241 - DNA, 30 bp, synthetic construct
  source 1..30: mol_type = other DNA; note = Description of Artificial Sequence: Synthetic polynucleotide
tccccgtggttctactacataatgtggccg

SEQ ID NO: 2242 - DNA, 30 bp, synthetic construct
  source 1..30: mol_type = other DNA; note = Description of Artificial Sequence: Synthetic polynucleotide
ttccacactccgttttggataatgttgaac

SEQ ID NO: 2243 - DNA, 30 bp, synthetic construct
  source 1..30: mol_type = other DNA; note = Description of Artificial Sequence: Synthetic polynucleotide
agggacatccccagctccatgctgtggtcg

SEQ ID NO: 2244 - DNA, 30 bp, synthetic construct
  source 1..30: mol_type = other DNA; note = Description of Artificial Sequence: Synthetic polynucleotide
agggacaacccctccgactcgccctaatcc

SEQ ID NO: 2245 - DNA, 30 bp, synthetic construct
  source 1..30: mol_type = other DNA; note = Description of Artificial Sequence: Synthetic polynucleotide
tcctagtagaagacaccctctcactgcccg

SEQ ID NO: 2246 - DNA, 30 bp, synthetic construct
  source 1..30: mol_type = other DNA; note = Description of Artificial Sequence: Synthetic polynucleotide
agtaccatgtacacccactctcccagtgcc

SEQ ID NO: 2247 - DNA, 30 bp, synthetic construct
  source 1..30: mol_type = other DNA; note = Description of Artificial Sequence: Synthetic polynucleotide
atatggacgttcatgctgatcaccataccg

SEQ ID NO: 2248 - DNA, 30 bp, synthetic construct
  source 1..30: mol_type = other DNA; note = Description of Artificial Sequence: Synthetic polynucleotide
agcaggagctccttggcctcagcgtgcgag

SEQ ID NO: 2249 - DNA, 30 bp, synthetic construct
  source 1..30: mol_type = other DNA; note = Description of Artificial Sequence: Synthetic polynucleotide
acaagcagcttcactatgacaaccactgac

SEQ ID NO: 2250 - DNA, 284 bp, synthetic construct
  source 1..284: mol_type = other DNA; note = Description of Artificial Sequence: Synthetic polynucleotide
  misc_difference 59: note = misc_feature - n is a, c, g, or t
  misc_difference 244: note = misc_feature - n is a, c, g, or t
cagcctaggaactggcttcctggaccctgttaccgccagcagagagtctcaamammavnsrvcsrsaacaacaacagtrasttctcctggmmaggagctaccaagtaccacctcaatggcagagactctctggtgaatcccggaccagctatggcaagccacrrggacrrcrmsrrsarsttttttcctcagagcggggttctcatctttgggaagsaarrcrscrvsrvarvcratrycgmsnhcrvmvrsgtcatgattacagacgaagaggagatctggac

SEQ ID NO: 2251 - DNA, 34 bp, synthetic construct
  source 1..34: mol_type = other DNA; note = Description of Artificial Sequence: Synthetic polynucleotide
tgggacaatggcggtcgtctctcagagttktkkt

SEQ ID NO: 2252 - DNA, 35 bp, synthetic construct
  source 1..35: mol_type = other DNA; note = Description of Artificial Sequence: Synthetic polynucleotide
agaggacckktcctcgatggttcatggtggagtta

SEQ ID NO: 2253 - DNA, 31 bp, synthetic construct
  source 1..31: mol_type = other DNA; note = Description of Artificial Sequence: Synthetic polynucleotide
ccacttagggcctggtcgataccgttcggtg

SEQ ID NO: 2254 - DNA, 32 bp, synthetic construct
  source 1..32: mol_type = other DNA; note = Description of Artificial Sequence: Synthetic polynucleotide
tctcgccccaagagtagaaacccttcsttyyg

SEQ ID NO: 2255 - protein, 735 aa, Adeno-associated virus 2 [sequence omitted]

SEQ ID NO: 2256 - protein, 736 aa, Adeno-associated virus 9; identical to SEQ ID NO: 123

SEQ ID NO: 2257 - protein, 7 aa, synthetic construct
  source 1..7: note = Description of Artificial Sequence: Synthetic polypeptide
GSTPPPM

SEQ ID NO: 2258 - protein, 7 aa, synthetic construct
  source 1..7: note = Description of Artificial Sequence: Synthetic polypeptide
GETRAPL

SEQ ID NO: 2259 - protein, 6 aa, synthetic construct
  source 1..6: note = Description of Artificial Sequence: Synthetic polypeptide
SPAKFA

SEQ ID NO: 2260 - protein, 6 aa, synthetic construct
  source 1..6: note = Description of Artificial Sequence: Synthetic polypeptide
NKDKLN

SEQ ID NO: 2261 - protein, 24 aa, Adeno-associated virus
YFLSRTNTTSGIETQSTLRFSQAG

SEQ ID NO: 2262 - protein, 7 aa, synthetic construct
SVSKPFL

SEQ ID NO: 2263 - DNA, 270 bp, Homo sapiens
  source 1..270: mol_type = genomic DNA
  misc_difference 1..270: note = This sequence may encompass 41-90 cag repeating units
cagcagcagcagcagcagcagcagcagcagcagcagcagcagcagcagcagcagcagcagcagcagcagcagcagcagcagcagcagcagcagcagcagcagcagcagcagcagcagcagcagcagcagcagcagcagcagcagcagcagcagcagcagcagcagcagcagcagcagcagcagcagcagcagcagcagcagcagcagcagcagcagcagcagcagcagcagcagcagcagcagcagcagcagcagcagcagcagcagcag

SEQ ID NO: 2264 - DNA, 120 bp, Homo sapiens
  source 1..120: mol_type = genomic DNA
  misc_difference 1..120: note = This sequence may encompass 36-40 cag repeating units
cagcagcagcagcagcagcagcagcagcagcagcagcagcagcagcagcagcagcagcagcagcagcagcagcagcagcagcagcagcagcagcagcagcagcagcagcagcagcagcag
